United States Patent Application Publication US 2007/0042392 A1 - sequence listing, part 3

SEQ ID NO: 3911 - protein, 240 aa, Homo sapiens
AGRGARAAGEGGGPFKSRPRPLPSSRSLPAVGGGRYGADKMAAGGAVAAAPECRLLPYALHKWSSFSSTYLPENILVDKPNDQSSRWSSESNYPPQYLILKLERPAIVQNITFGKYEKTHVCNLKKFKVFGGMNEENMTELLSSGLKNDYNKETFTLKHKIDEQMFPCRFIKIVPLLSWGPSFNFSIWYVELSGIDDPDIVQPCLNWYSKYREQEAIRLCLKHFRQHNYTEAFESLQKKT

SEQ ID NO: 3912 - protein, 153 aa, Homo sapiens
FEKKQLRRPSLFLLGCCSFGIMAPSLWKGLEGIGLFALAHAAFSAAQHRSYMRLTEKEDESLPIDIVLQTLLAFAVTCYGIVHIAGEFKDMDATSELKNKTFDTVRNHPSFYVFNHRGSEYFSGPSDTANSSNQDALSSNTSLKLRKLESLRR

SEQ ID NO: 3913 - protein, 114 aa, Homo sapiens
APGRPEAKVPERSRESGSRRVRGPLLQLRPGRTSRPASGRGRGGAGGSYGKMRKPDSKIVLLGDMNVGKTSLLQRYMERRFPDTVSTVGGAFYLKQWRSYNISIWDTAGEAGAA

SEQ ID NO: 3914 - protein, 2515 aa, Homo sapiens
PGIRVGITSQTGLSSNLQENCSKLAFISSHGTEKQLQCMPMEGRGRASSSISDLQGKGFEKGTGEKHVPGVGSARHSPQASAGGSPWQRGKAQTRWLGKPDPGRKRRRGSPQEEGGLRVSAAARLLCSGANRCKVLVRQNSTPNTQQPAVHPSTPPSRPLPQAGRCLVAPLRPHPDWVAAKTLAKALRAPGKPWRLAAPSPLGDLGAPGLPGPSTAPRTLSVEEPGVECNQLCLYADVTDPVLCLGQKDPGVEGKHCEKEKISSSKELKHVHAKSEPSKPARRLSESLHVVDENKNESKIEREHKRRTSTPVIMEGVQEETDTRDVKRQVERSEICTEEPQKQKSTLKNEKHLKKDDSETPHLKSLLKKEVKSSKEKPEREKTPSEDKLSVKHKYKGDCMHKTGDETELHSSEKGLKVEENIQKQSQQTKLSSDDKTERKSKHRNERKLSVLGKDGKPVSEYIIKTDENVRKENNKKERRLSAEKTKAEHKSRRSSDSKIQKDSLGSKQHGITLQRRSESYSEDKCDMDSTNMDSNLKPEEVVHKEKRRTKSLLEEKLVLKSKSKTQGKQVKVVETELQEGATKQATTPKPDKEKNTEENDSEKQRKSKVEDKPFEETGVEPVLETASSSAHSTQKDSSHRAKLPLAKEKYKSDKDSTSTRLERKLSDGHKSRSLKHSSKDIKKKDENKSDDKDGKEVDSSHEKARGNSSLMEKKLSRRLCENRRGSLSQEMAKGEEKLAANTLSTPSGSSLQRPKKSGDMTLIPEQEPMEIDSEPGVENVFEVSKTQDNRNNNSHQDIDSENMKQKTSATVQKDELRTCTADSKATAPAYKPGRGTGVNSNSEKHADHRSTLTKKMHIQSAVSKMNPGEKEPIHRGTTEVNIDSETVHRMLLSAPSENDRVQKNLKNTAAEEHVAQGDATLEHSTNLDSSPSLSSVTVVPLRESYDPDVIPLFDKRTVLEGSTASTSPADHSALPNQSLTVRESEVLKTSDSKEGGEGFTVDTPAKASITSKRHIPEAHQATLLDGKQGKVIMPLGSKLTGVIVENENITKEGGLVDMAKKENDLNAEPNLKQTIKATVENGKKDGIAVDHVVGLNTEKYAETVKLKHKRSPGKVKDISIDVERRNENSEVDTSAGSGSAPSVLHQRNGQTEDVATGPRRAEKTSVATSTEGKDKDVTLSPVKAGPATTTSSETRQSEVALPCTSIEADEGLIIGTHSRNNPLHVGAEASECTVFAAAEEGGAVVTEGFAESETFLTSTKEGESGECAVAESEDRAADLLAVHAVKIEANVNSVVTEEKDDAVTSAGSEEKCDGSLSRDSEIVEGTITFISEVESDGAVTSAGTEIRAGSISSEEVDGSQGNMMRMGPKKETEGTVTCTGAEGRSDNFVICSVTGAGPREERMVTGAGVVLGDNDAPPGTSASQEGDGSVNDGTEGESAVTSTGITEDGEGPASCTGSEDSSEGFAISSESEENGESAMDSTVAKEGTNVPLVAAGPCDDEGIVTSTGAKEEDEEGEDVVTSTGRGNEIGHASTCTGLGEESEGVLICESAEGDSQIGTVVEHVEAEAGAAIMNANENNVDSMSGTEKGSKDTDICSSAKGIVESSVTSAVSGKDEVTPVPGGCEGPMTSAASDQSDSQLEKVEDTTISTGLVGGSYDVLVSGEVPECEVAHTSPSEKEDEDIITSVENEECDGLMATTASGDITNQNSLAGGKNQGKVLIISTSTTNDYTPQVSAITDVEGGLSDALRTEENMEGTRVTTEEFEAPMPSAVSGDDSQLTASRSEEKDECAMISTSIGEEFELPISSATTIKCAESLQPVAAAVEERATGPVLISTADFEGPMPSAPPEAESPLASTSKEEKDECALISTSIAEECEASVSGVVVESENERAGTVMEEKDGSGIISTSSVEDCEGPVSSAVPQEEGDPSVTPAEEMGDTAMISTSTSEGCEAVMIGAVLQDEDRLTITRVEDLSDAAIISTSTAECMPISASIDRHEENQLTADNPEGNGDLSATEVSKHKVPMPSLIAENNCRCPGPVRGGKEPGPVLAVSTEEGHNGPSVHKPSAGQGHPSAVCAEKEEKHGKECPEIGPFAGRGQKESTLHLINAEEKNVLLNSLQKEDKSPETGTAGGSSTASYSAGRGLEGNANSPAHLRGPEQTSGQTAKDSSVSSIRYLAAVNTGAIKADDMPPVQGTVAEHSFLPAEQQGSEDNLKTSTTKCITGQESKIAPSHTMIPPATYSVALLAPKCEQDLTIKNDYSGKWTDQASAEKTGDDNSTRKSFPEEGDIMVTVSSEENVCDIGNEESPLNVLGGLKLKANLKMEAYVPSEEEKNGEILAPPESLCGGKPSGIAELQREPLLVNESLNVENSGFRTNEEIHSESYNKGEISSGRKDNAEAISGHSVEADPKEVEEEERHMPKRKRKQHYLSSEDEPDDNPDVLDSRIETAQRQCPETEPHATKEENSRDLEELPKTSSETNSTTSRVMEEKDEYSSSETTGEKPEQNDDDTIKSQE

SEQ ID NO: 3915 - protein, 2515 aa, Homo sapiens; identical to SEQ ID NO: 3914

SEQ ID NO: 3916 - protein, 257 aa, Homo sapiens
GPFGVLWPSAKPGPVTAVEARPPDASDPEGLRGGSPAPLLAPGPLDPSGRLHPAVSMMSYLKQPPYGMNGLGLAGPAMDLLHPSVGYPATPRKQRRERTTFTRSQLDVLEALFAKTRYPDIFMREEVALKINLPESRVQVWFKNRRAKCRQQQQSGSGTKSRPAKKKSSPVRESSGSESSGQFTPPAVSSSASSSSSASSSSANPAAAAAAGLVVAKLPCPLHIFSLCVFIEENRLVSGSWARDIRSVEETDKSGYR

SEQ ID NO: 3917 - protein, 258 aa, Homo sapiens
RNIPGRRFRPPGLRRLLKGPHMPREPRGYRTRVPALRELVPSSHAGSGASEHCQNNRQGSRQHRASRNVQAGGALAPPRHLCGLCSRLHFLKPDLSVRAAPSRAGASVMALRKELLKSIWYAFTALDVEKSGKVSKSQLRVLSHNLYTVLHIPHDPVALEEHFRDDDDGPVSSQGYMPYLNKYILDKVEEGAFVKEHFDELCWTLTAKKNYRADSNGNSMLSNQDAFRLWCLFNFLSEDKYPLIMDPDEGEYLLKRYS

SEQ ID NO: 3918 - protein, 103 aa, Homo sapiens
WQDLVCLGGSRAQEQKPLQQLWNAILLVAMLLCTGLVVQAQRQASRQSQRELGGQVDLFKRRVVRRLASLKTRRCRLSRAAQGLPDPGAETCAVCLDYFCNKQ

SEQ ID NO: 3919 - protein, 68 aa, Homo sapiens
RVLTAINHTLKENLRKFYKGKKDKPLDLRPKKTRAMRRRLNMHEENLKTKKQHRKERLYPLRKYAAKA

SEQ ID NO: 3920 - protein, 218 aa, Homo sapiens
RCCRSFVAPLQEKVVFGLFFLGAILCLSFSWLFHTVYCHSEGVSRLFSKLDYSGIALLIMGSFVPWLYYSFYCNPQPCFIYLIVICVLGIAAIIVSQWDMFATPQYRGVRAGVFLGLGLSGIIPTLHYVISEGFLKAATIGQIGWLMLMASLYITGAALYAARIPERFFPGKCDIWFHSHQLFHIFVVAGAFVHFHGVSNLQEFRFMIGGGCSEEDAL

SEQ ID NO: 3921 - protein, 378 aa, Homo sapiens
LERDGCGGEEGGSVRSGAGPDSDPRGASSPPAGHRGTAASPRPVAAPSRTPAPPHTRARASPGLPSGPAWRRVQWFSRVSGQVSTLMKATVLMRQPGRVQEIVGALRKGGGDRLQVISDFDMTLSRFAYNGKRCPSSYNILDNSKIISEECRKELTALLHHYYPIEIDPHRTVKEKLPHMVEWWTKAHNLLCQQKIQKFQIAQVVRESNAMLREGYKTFFNTLYHNNIPLFIFSAGIGDILEEIIRQMKVFHPNIHIVSNYMDFNEDGFLQGFKGQLIHTYNKNSSACENCGYFQQLEGKTNVILLGDSIGDLTMADGVPGVQNILKIGFLNDKVEERRERYMDSYDIVLEKDETLDVVNGLLQHILCQGVQLEMQGP

SEQ ID NO: 3922 - protein, 54 aa, Homo sapiens
GKIYQRAFGGHSLKFGKGVQAHGCCCVADRTGHSILHTSYGRERPAPVHLRQDT

SEQ ID NO: 3923 - protein, 1085 aa, Homo sapiens
EHATHAYAKLGTRRRHREVTVFVPTWQLKKNRRVRESHFLTKLHSLKMLSITPSQLENGKKITTYDYRFMVKLAEETDGIIVTNEQIHILMNSSKKLMVKDRLLPFTFAGNLFMVPDDPLGRDGPTLDEFLKKPNRLDTDIGNFLKVWKTLPPSSASVTELSDDADSGPLESLPNMEEVREEKEERQDEEQRQGQGTQKAAEEDDLDSSLASVFRVECPSLSEEILRCLSLHDPPDGALDIDLLPGAASPYLGIPWDGKAPCQQVLAHLAQLTIPSNFTALSFFMGFMDSHRDAIPDYEALVGPLHSLLKQKPDWQWDQEHEEAFLALKRALVSALCLMAPNSQLPFRLEVTVSHVALTAILHQEHSGRKHPIAYTSKPLLPDEESQGPQSGGDSPYAVAWALKHFSRCIGDTPVVLDLSYASRTTADPEVREGRRVSKAWLIRWSLLVQDKGKRALELALLQGLLGENRLLTPAASMPRFFQVLPPFSDLSTFVCIHMSGYCFYREDEWCAGFGLYVLSPTSPPVSLSFSCSPYTPTYAHLAAVACGLERFGQSPLPVVFLTHCNWIFSLLWELLPLWRARGFLSSDGAPLPHPSLLSYIISLTSGLSSLPFIYRTSYRGSLFAVTVDTLAKQGAQGGGQWWSLPKDVPAPTVSPHAMGKRPNLLALQLSDSTLADIIARLQAGQKLSGSSPFSSAFNSLSLDKESGLLMFKGDKKPRVWVVPTQLRRDLIFSVHDIPLGAHQRPEETYKKLRLLGWWPGMQEHVKDYCRSCLFCIPRNLIGSELKVIESPWPLRSTAPWSNLQIEVVGPVTISEEGHKHVLIVADPNTRWVEAFPLKPYTHTAVAQVLLQHVFARWGVPVRLEAAQGPQFARHVLVSCGLALGAQVASLSRDLQFPCLTSSGAYWEFKRALKEFIFLHGKKWAASLPLLHLAFRASSTDATPFKVLTGGESRLTEPLWWEMSSANIEGLKMDVFLLQLVGELLELHWRVADKASEKAENRRFKRESQEKEWNVGDQVLLLSLPRNGSSAKWVGPFYIGDRLSLSLYRIWGFPTPEKLGCIYPSSLMKAFAKSGTPLSFKVLEQ

SEQ ID NO: 3924 - protein, 608 aa, Homo sapiens
MGSVTVRYFCYGCLFTSATWTVLLFVYFNFSEVTQPLKNVPVKGSGPHGPSPKKFYPRFTRGPSRVLEPQFKANKIDDVIDSRVEDPEEGHLKFSSELGMIFNERDQELRDLGYQKHAFNMLISDRLGYHRDVPDTRNAACKEKFYPPDLPAASVVICFYNEAFSALLRTVHSVIDRTPAHLLHEIILVDDDSDFDDLKGELDEYVQKYLPGKIKVIRNTKREGLIRGRMIGAAHATGEVLVFLDSHCEVNVMWLQPLLAAIREDRHTVGCPVIDIISADTLAYSSSPVVRGGFNWGLHFKWDLVPLSELGRAEGATAPIKSPTMAGGLFAMNRQYFHELGQYDSGMDIWGGENLEISFRIWMCGGKLFIIPCSRVGHIFRKRRPYGSPEGQDTMTHNSLRLAHVWLDEYKEQYFSLRPDLKTKSYGNISERVELRKKLGCKSFKWYLDNVYPEMQISGSHAKPQQPIFVNRGPKRPKVLQRGRLYHLQTNKCLVAQGRPSQKGGLVVLKACDYSDPNQIWIYNEEHELVLNSLLCLDMSETRSSDPPRLMKCHGSGGSQQWTFGKNNRLYQVSVGQCLRAVDPLGQKGSVAMAICDGSSSQQWHLEG

SEQ ID NO: 3925 - protein, 829 aa, Homo sapiens
VRWNSKTECYLSIQTQENFPANLNELVNCIVISSLVTTQRKLKAMSLLGSRNQLARAVLNPNPMDFCTKDLLTTTSERIIAYLRDFNEDQKKAIETAYAMVKHSPSVAKICLIHGPPGTGKSKTIVGLLYRLLTENQRKGHSDENSNAKIKQNRVLVCAPSNAAVDELMKKIILEFKEKCKDKKNPLGNCGDINLVRLGPEKSINSEVLKFSLDSQVNHRMKKELPSHVQAMHKRKEFLDYQLDELSRQRALCRGGREIQRQELDENISKVSKERQELASKIKEVQGRPQKTQSIIILESHIICCTLSTSGGLLLESAFRGQGGVPFSCVIVDEAGQSCEIETLTPLIHRCNKLILVGDPKQLPPTVISMKAQEYGYDQSMMARFCRLLEENVEHNMISRLPILQLTVQYRMHPDICLFPSNYVYNRNLKTNRQTEAIRCSSDWPFQPYLVFDVGDGSERRDNDSYINVQEIKLVMEIIKLIKDKRKDVSFRNIGIITHYKAQKTMIQKDLDKEFDRKGPAEVDTVDAFQGRQKDCVIVTCVRANSIQGSIGFLASLQRLNVTITRAKYSLFILGHLRTLMENQHWNQLIQDAQKRGAIIKTCDKNYRHDAVKILKLKPVLQRSLTHPPTIAPEGSRPQGGLPSSKLDSGFAKTSVAASLYHTPSDSKEITLTVTSKDPERPPVHDQLQDPRLLKRMGIEVKGGIFLWDPQPSSPQHPGATPPTGEPGFPVVHQDLSHVQQPAAVVAALSSHKPPVRGEPPAASPEASTCQSKCDDPEEELCHRREARAFSEGEQEKCGSETHHTRRNSRWDKRTLEQEDSSSKKRKLL

SEQ ID NO: 3926 - protein, 62 aa, Homo sapiens
MPREDRATWKSNYFLKIIQLLDDYPKRFIVGANNVGSKQMQQIRMSLRGKAVVLMGKNTMMR

SEQ ID NO: 3927 - protein, 179 aa, Homo sapiens
AHLLMLNLALTDLLYLTSLPFLIHYYASGENWIFGDFMCKFIRFSFHFNLYSSILFLTCFSIFRYCVIIHPMSCFSIHKTRCAVVACAVVWIISLVAVIPMTFLITSTNRTNRSACLDLTSSDELNTIKWYNLILTALLCLPLVIVTLCYTTIIHTLTHGHANDSCLKQKARRLTILLL

SEQ ID NO: 3928 - protein, 505 aa, Homo sapiens
GEEAVGGGAEGGGFGVGAQGRAGGRGVEAGRMRLSKTLVDMDMADYSAALDPAYTTLEFENVQVLTMGNDTSPSEGTNLNAPNSLGVSALCAICGDRATGKHYGASSCDGCKGFFRRSVRKNHMYSCRFSRQCVVDKDKRNQCRYCRLKKCFRAGMKKEAVQNERDRISTRRSSYEDSSLPSINALLQAEVLSRQITSPVSGINGDIRAKKIASIADVCESMKEQLLVLVEWAKYIPGFCELPLDDQGALLRAHAGEHLLLGATKRSMVFKDVLLLGNDYIVPRHCPELAEMSRVSIRILDELVLPFQELQIDDNEYAYLKAIIFFDPDAKGLSDPGKIKRLRSQVQVSLEDYINDRQYDSRGRFGELLLLLPTLQSITWQMIEQIQFIKLFGMAKIDNLLQEMLLGGSPSDAPHAHHPLHPHLMQEHMGTNVIVANTMPTHLSNGQMCEWPRPRGQAATPETPQPSPPGASGSEPYKLLPGAVATIVKPLSAIPQPTITKQEVI

SEQ ID NO: 3929 - protein, 927 aa, Homo sapiens
RVLSLESPLEKDPRVLGAQSVPRGRALKGLSPLGLDSAFRLFPDPRAGPWNTAVLSSGMEPETALWGPDLQGPEQSPNDAHRGAESENEEESPRQESSGEEIIMGDPAQSPESKDSTEMSLERSSQDPSVPQNPPTPLGHSNPLDHQIPLDPPAPEVVPTPSDWTKACEASWQWGALTTWNSPPVVPANEPSLRELVQGRPAGAEKPYICNECGKSFSQWSKLLRHQRIHTGERPNTCSECGKSFTQSSHLVQHQRTHTGEKPYKCPDCGKCFSWSSNLVQHQRTHTGEKPYKCTECEKAFTQSTNLIKHQRSHTGEKPYKCGECRRAFYRSSDLIQHQATHTGEKPYKCPECGKRFGQNHNLLKHQKIHAGEKPYRCTECGKSFIQSSELTQHQRTHTGEKPYECLECGKSFGHSSTLIKHQRTHLREDPFKCPVCGKTFTLSATLLRHQRTHTGERPYKCPECGKSFSVSSNLINHQRIHRGERPYICADCGKSFIMSSTLIRHQRIHTGEKPYKCSDCGKSFIRSSHLIQHRRTHTGEKPYKCPECGKSFSQSSNLITHVRTHMDENLFVCSDCGKAFLEAHELEQHRVIHERGKTPARRAQGDSLLGLGDPSLLTPPPGAKPHKCLVCGKGFNDEGIFMQHQRIHIGENPYKNADGLIAHAAPKPPQLRSPRLPFRGNSYPGAAEGRAEAPGQPLKPPEGQEGFSQRRGLLSSKTYICSHCGESFLDRSVLLQHQLTHGNEKPFLFPDYRIGLGEGAGPSPFLSGKPFKCPECKQSFGLSSELLLHQKVHAGGKSSHKSPELGKSSSVLLEHLRSPLGARPYRCSDCRASFLDRVALTRHQETHTQEKPPNPEDPPPEAVTLSTDQEGEGETPTPTESSSHGEGQNPKTLVEEKPYLCPECGAGFTEVAALLLHRSCHPGVSL

SEQ ID NO: 3930 - protein, 79 aa, Homo sapiens
KTQETHIYISEHIFFPFLQGFGNLPICMAKTDLSLSHQPDKKGVPSDFILPISDVRASIGAGFIYPLVGTGSRESPLWL

SEQ ID NO: 3931 - protein, 96 aa, Homo sapiens
KRRDFLSCWPAFTVLGEARGDQVDWSKLYRDTGLVKMSRKPRASSPFSNNHPSTPKRRGRGKHPLIPGPEALSKFPRQPIREKGPVKEVPGTKGSP

SEQ ID NO: 3932 - protein, 96 aa, Homo sapiens; identical to SEQ ID NO: 3931

SEQ ID NO: 3933 - protein, 515 aa, Homo sapiens
STHASEHWDSALQLAKHLAPDQIPFISKEYAIQLEFAGDYVNALAHYEKGITGDNKEHDEACLAGVAQMSIRMGDIRRGVNQALKHPSRVLKRDCGAILENMKQFSEAAQLYEKGLYYDKAASVYIRSKNWAKVGDLLPHVSSPKIHLQYAKAKEADGRYKEAVVAYENAKQWQSVIRIYLDHLNNPEKAVNIVRETQSLDGAKMVARFFLQLGDYGSAIQFLVMSKCNNEAFTLAQQHNKMEIYADIIGSEDTTNEDYQSIALYFEGEKRYLQAGKFFLLCGQYSRALKHFLKCPSSEDNVAIEMAIETVGQAKDELLTNQLIDHLLGENDGMPKDAKYLFRLYMALKQYREAAQTAIIIAREEQSAGNYRNAHDVLFSMYAELKSQKIKIPSEMATNLMILHSYILVKIHVKNGDHMKGARMLIRVANNISKFPSHIVPILTSTVIECHRAGLKNSAFSFAAMLMRPEYRSKIDAKYKKKIEGMVRRPDISEIEEATTPCPFCKFLLPESELL

SEQ ID NO: 3934 - protein, 311 aa, Homo sapiens
PTRRPILPLTSPKAISVPSPLQGKQHTLVKSCLSVSGIGGFLVSLSSRMKLQTLAVSVTALKFWSAYVPCQTQDRDALRLTLEQIDLIRRMCASYSELELVTSAKALNDTQKLACLIGVEGGHSLDNSLSILRTFYMLGVRYLTLTHTCNTPWAESSAKGVHSFYNNISGLTDFGEKVVAEMNRLGMMVDLSHVSDAVARRALEVSQAPVIFSHSAARGVCNSARNVPDDILQLLEEERWAFVMVSLFHGELIQWQPIRPMCSTVADHFDHIKAVIGSKFIGIGGDYDGAGKYRKKTTCKAPWRTSSRMSS

SEQ ID NO: 3935 - protein, 294 aa, Homo sapiens
HETTPAVVQSVLLERGWNKFDKQEQNAEDWNLYWRTSSFRMTEHNSVKPWQQLNHHPGTTKLTRKDCLAKHLKHMRRMYGTSLYQFIPLTFVMPNDYTKFVAEYFQERQMLGTKHSYWICKPAELSRGRGILIFSDFKDFIFDDMYIVQKYISNPLLIGRYKCDLRIYVCVTGFKPLTIYVYQEGLVRFATEKFDLSNLQNNYAHLTNSSINKSGASYEKIKEVIGHGCKWTLSRFFSYLRSWDVDDLLLWKKIHRMVILTILAIAPSVPFAANCFELFGFDILIDDNEFHRTG

SEQ ID NO: 3936 - protein, 79 aa, Homo sapiens
HLAHSLGPLPKHYQYCVRYLYYQVTKDVIKEFADDGVKYLELRSTPRRENATGMTKKTYVESILEGIKQSKQENLDIDV

SEQ ID NO: 3937 - DNA, 1633 bp, Homo sapiens
  CDS (292)..(1431)
agcccatggactctgggtccccgaaggacatctcaggaaccccctagttctctactttgagacatatgcggtggctggggtcactctgagaagtgtcactttggacttgtcccttgcgttgggtgatggagtcagacaccaccagcagtggatggccaagcttcaagggcaccttcttagcagctctgtgggctgtgggcaaaagactttcctgttctcccttctccatattagggacccagggaagtgcttgctgcttccagcctcgctgatggctctgaggagcaggtgatggctgtggcattggtgagagaaagggacctgtcatttccaggggtgggtgatgctgtggtaaaccccacaaggtggcacttgcctgcccagcctgagatgctgtatgagggcggtgagggaaggatggagacgctgaaggataagaccctgcaggagctggaggagttgcagaatgactcggaggcgattgaccagctggccctggagtcccctgaggtccaggacctacagctggaacgggagatggcactggccaccaaccggagcctggcagagcggaacttggagttccagggtcccctggagatcagccgctcaaacctctcggatagataccaggagctccggaagctcgtggagcggtgccaggagcagaaggcaaagctggagaaattttcttcagcactgcagccagggaccttgttagaccttctgcaggtggaaggcatgaagatcgaagaagagtccgaggccatggctgagaagttcctggagggcgaggtgcccctggaaacgttcctggagaatttttcctccatgaggatgctgtcccacctgcgccgggttcgcgtggaaaagctccaggaagtggtgaggaagcccagggcttcccaggagctggccggcgatgcccctccaccccgtccaccacccccggtgcgcccagtcccccagggaacaccccctgtggttgaagagcagccgcagccaccattagccatgcctccctaccctttgccctacagcccatcccccagcctgcctgtgggccccactgcccatggagccctgccaccggcccctttcccagtagtgtcccagccctccttctacagcgggcctctgggccccacttacccggcagcccagcttggacccagggtcccacccacgctcaacctttggcccagccatcgccgagattcgagggtcaactggaagtggcgttggtgctccctgtggacttgcgtcggcacccagaggccttggagggacaaggcactgggcggtgtgactggtcatggcacttgctggccttctggccagaggtcctcctggaagcccctcctttcagtgcctggctgcagcggtgctagccaggctggagtccagcacctctcgccggtgtctgtgtgagtgagcgcatgtgcgcatttatgagcatctacttgcggctgcactcagggccatttgaacccagtgcagagttatctctatgaggaggccccgggtctccagccccctccatctcccctggggtttggcatatttgacatggagccccatgccaagggatgcagcttgttgtggcttgtcaatccattcaagctagcctgcc

SEQ ID NO: 3938 - DNA, 2914 bp, Homo sapiens
  CDS (1)..(2583)
atggaaatcggctccgcaggacccgctggggcccagcccctactcatggtgcccagaagacctggctatggcgccatgggcaaacccattaaactgctggctaactgttttcaagttgaaatcccaaagattgatgtctacctctatgaggtagatattaaaccagacaagtgtcctaggagagtgaacagggaggtggttgactcaatggttcagcattttaaagtaactatatttggagaccgtagaccagtttatgatggaaaaagaagtctttacaccgccaatccacttcctgtggcaactacaggggtagatttagacgttactttacctggggaaggtggaaaagatcgacctttcaaggtgtcaatcaaatttgtctctcgggtgagttggcacctactgcatgaagtactgacaggacggactttgcctgagccactggaattagacaagccaatcagcactaaccctgtccatgccgttgatgtggtgctacgacatctgccctccatgaaatacacacctgtggggcgttcatttttctccgctccagaaggatatgaccaccctctgggagggggcagggaagtgtggtttggattccatcagtctgttcggcctgccatgtggaaaatgatgcttaatatcgatgtttctgccactgccttctacaaagcacaacctgtaattcagttcatgtgtgaagttcttgatattcataatattgatgagcaaccaagacctctgactgattctcatcgggtaaaattcaccaaagagataaaaggtttgaaggttgaagtgactcattgtggaacaatgagacggaaataccgtgtttgtaatgtaacaaggaggcctgccagtcatcaaacctttcctttacagttagaaaacggccaaactgtggagagaacagtagcgcagtatttcagagaaaagtatactcttcagctgaagtacccgcaccttccctgtctgcaagtcgggcaggaacagaaacacacctacctgccactagaagtctgtaatattgtggcagggcaacgatgtatcaagaagctaacagacaatcagacttccactatgatcaaggcaacagcaagatctgcaccagatagacaagaggaaattagcagattggtaagaagtgcaaattatgaaacagatccatttgttcaggagtttcaatttaaagttcgggatgaaatggctcatgtaactggacgcgtacttccagcacctatgctccagtatggaggacggaatcggacagtagcaacaccgagccatggagtatgggacatgcgagggaaacaattccacacaggagttgaaatcaaaatgtgggctatcgcttgttttgccacacagaggcagtgcagagaagaaatattgaagggtttcacagaccagctgcgtaagatttctaaggatgcagggatgcccatccagggccagccatgcttctgcaaatatgcacagggggcagacagcgtagagcccatgttccggcatctcaagaacacatattctggcctacagcttattatcgtcatcctgccggggaagacaccagtgtatgcggaagtgaaacgtgtaggagacacacttttgggtatggctacacaatgtgttcaagtcaagaatgtaataaaaacatctcctcaaactctgtcaaacttgtgcctaaagataaatgttaaactcggagggatcaataatattcttgtacctcatcaaagaccttctgtgttccagcaaccagtgatctttttgggagccgatgtcactcatccacctgctggtgatggaaagaagccttctattgctgctgttgtaggtagtatggatgcacacccaagcagatactgtgccacagtaagagttcagagaccccgacaggagatcatccaggacttggcctccatggtccgggaacttcttattcaattttataagtcaactcggttcaagcctactcgtatcatcttttatcgggatggtgtttcagaggggcagtttaggcaggtattatattatgaactactagcaattcgagaagcctgcatcagtttggagaaagactatcaacctggaataacctacattgtagttcagaagagacatcacactcgattattttgtgctgataggacagaaagggttggaagaagtggcaatatcccagctggaacaacagttgatacagacattacacacccatatgagttcgatttttacctctgtagccatgctggaatacagggtaccagtcgtccttcacactatcatgttttatgggatgataactgctttactgcagatgaacttcagctgctaacttaccagctctgccacacttacgtacgctgtacacgatctgtttctatacctgcaccagcgtattatgctcacctggtagcatttagagccagatatcatcttgtggacaaagaacatgacagtgctgaaggaagtcacgtttcaggacaaagcaatgggcgagatccacaagctcttgccaaggctgtacagattcaccaagataccttacgcacaatgtacttcgcttaaatagtccaagtatattctctgagaggaagtactgaaagatgaattgacatacaacgtatgtttccagtgaagtcaattgagtaaggacacctccagccatacagaaaccaacactgtgtgggggccaaggtctgatccttatgttaatacaaggaagattgtttacttcatcaaggaacacagcatcattatgcaatatgaaaccagccaactgctttttgtgcggtctcctataggaagtatcgcaattgttttgttttcatttcttgtagtctaacccttttaatgcctttacctcaagttgcttggcagcacaactatctttgcaaaa

SEQ ID NO: 3939 - DNA, 5640 bp, Homo sapiens
  CDS (88)..(5412)
gtccttcgagtgtattatgaccgccttctggacaatacagacagaagctggctcatcaactacattcaagaaattttgagaaactacatgtatgaagattttcatgagctttttcagcgtttggattttgataatgatggcatggtggaagcagatgacttacgcagcttaatgttttgtgatttccatgatcccaagagggaggataccaactacagagaaatcgcagatgtggataatcttcgaatgatagtagaaattcacctagaagaatacaacaatataagcaaaaaacccatgaaccttgtcttgtttcgatttgccatagagcacatcagcagaatttccaggatcctgaagcagcctcgcagccatgctctcctagtaggggttggagggagtggaaggcagtctgtcaccagattagctgcccacatggctgattattcagttttccaagttgaaatctctaaggggtatgatactactgaatggcatgaagatttaaaagtgatcttaaggaaatgtgcggaagatactcaaattaaagaagagtcttttctggaagatgtcagtaatctgctaaatgctggggagattccaaatctctttgcattagatgagaagcaagagatatgtgataagatgcgtcagttagatcgccagcgggataaaaccaagcaaacagatggcagccccatagcccttttcaacatgtttattgatcattgccgcagccaactgcatgtggtccttgccatgagtcccattggagatgcatttcggaatcgtcttagaaagttccctgctcttgttaactgctgtaccattgactggtttcagtcatggcctgaagatgcactccaggcagttgcctcacgattcttggaagaaattgaaatgtcagaggaaatacgagatggctgtatcgacatgtgtaaaagcttccacacttctactatagatttatccaaatctttctttgttgaacttcaaagatacaattatgtgactcctacctcttacctcgaattaatctccaccttcaaactgttgttagaaaagaaaagaagtgaagtaatgaaaatgaaaaagagatatgaagtgggtttggagaaactggattctgcttcatctcaagtagccacaatgcagatggagttggaggcactacatcctcaattaaaagttgctagcaaagaggttgatgaaatgatgataatgattgagaaagagtctgtagaagttgccaaaactgaaaaaatagtgaaagctgatgaaacaatagcgaatgaacaagctatggcttccaaagccatcaaagatgagtgcgatgctgacctggcaggtgccttgccaatattagagtcagcactggccgcccttgatactcttactgcacaggatattacagtggtaaaatccatgaagagtcctcctgctggtgtcaagcttgttatggaagctatatgcatcttgaaaggaatcaaagctgacaaaatccctgacccaacaggttcagggaaaaaaattgaggatttctggggcccagctaagagacttcttggtgacatgaggtttctgcagtcacttcatgaatatgacaaggacaatattcctccagcttatatgaatatcataagaaaaaattatattccaaatccagattttgtaccagaaaaaatcagaaatgcttctacagcggccgaaggtctgtgcaaatgggtcatagcaatggattcatatgataaagtggcaaaaatagtagctcccaaaaagataaaactggctgcagctgaaggggagcttaaaattgccatggatggtcttagaaagaagcaggcagcccttaaggaagttcaggacaagctggccaggcttcaagacacacttgaattaaataaacaaaagaaggctgacctggaaaaccaggttgacctttgcagcaaaaaactagaacgagctgaacagttgattggaggccttggaggtgagaaaactcgatggagccacacagctctggagctaggtcagctgtacatcaacttgactggggatatcctcatttcctccggagtggttgcttacctcggagccttcacatccacctatagacagaatcaaactaaagagtggacaactttgtgcaaaggaagagatatcccctgctcagatgattgctctcttatgggtaccctgggagaagctgtgacaattcgaacttggaatattgctggattaccttctgactcattttccattgataatgggataatcataatgaatgcaagaaggtggcctctgatgatagatcctcaaagtcaggctaataaatggatcaagaacatggaaaaagccaatagtctttatgtgattaaacttagtgaacctgactatgtcaggactctggaaaattgcatccagtttggtactcctgtgttgctagaaaatgttggcgaagaactagatcctattttggaacctcttctactaaaacaaacctttaagcagggtgggagtacatgtatccggcttggggactccacaattgaatatgcacctgacttccgcttctatattactaccaagttaagaaatcctcattatcttcctgaaacatcagtaaaggtaacattattaaacttcatgataacccctgagggaatgcaagatcagcttctgggaattgtggtggcacaagaaaggccagaccttgaagaagaaaagcaagccttgatattacaaggagctgaaaataaaaggcagttaaaagaaatagaagacaagattttagaagttctttcatcttcggaaggcaatatattagaagatgaaactgctattaagatattatcttcctccaaggccttggctaatgagatttctcagaagcaggaagtagccgaagagacagagaaaaagattgacaccacccgcatgggctatcgtcctattgccatccattcttccatcctatttttttctcttgctgatttagccaacattgagcccatgtaccagtattcactgacctggtttattaaccttttcatcctgtctattgaaaattcagagaaatcagaaattttggcaaaaaggcttcagattctcaaggatcactttacttattcactgtatgttaatgtctgccggtcactctttgaaaaggataagctgctcttttccttttgtctaaccataaatctactgctgcatgagcgggcgattaataaagctgagtggagatttctgctaactggtggcattggactggataatccttatgccaacccttgtacatggcttcctcagaaatcctgggatgaaatatgtcgattagatgatttgcctgccttcaaaaccattcgtagagagtttatgcgcttaaaggatggatggaagaaagtatatgatagtttggaaccacaccatgaggttttccctgaagaatgggaagataaagcaaatgagtttcaaaggatgcttattattcgttgcttgaggccagacaaggttattccaatgttgcaggaatttataatcaacagattgggacgtgcattcattgaaccacccccctttgatttagccaaggcatttggagacagtaactgctgtgcaccactgattttcgtgctctctcctggagcagatcccatggctgcccttctaaaatttgctgatgaccagggatatgggggatcaaaacttagctctttatctcttggtcaaggccaagggcccattgctatgaagatgttagaaaaagctgtcaaggaaggaacatgggttgttcttcagaattgtcaccttgccacctcttggatgccaacccttgagaaagtctgtgaggagttaagcccagagtcaacacatccagatttccgaatgtggctaacgagttacccatctccaaatttccctgtgtcagtactgcagaatggagtgaaaatgaccaatgaagcaccaaaaggtttacgggctaatatcattcgatcatacctcatggacccgatctctgatccggagttctttggcagctgcaaaaagcctgaggaattcaagaaattgctttatggcctgtgtttctttcatgctttggtacaagaaagacggaaatttggacccctagggtggaatattccttatgagttcaatgagacagatctgagaatcagcgtacagcagctccacatgttcctgaaccagtatgaggaactgccgtatgaggctctgcggtacatgactggcgaatgcaattacggaggtagagtgaccgatgactgggaccggcgcacgctgcgcagcattctaaacaaattcttcaatcccgaattagttgaaaattcagactataagttcgactcaagtggcatctattttgttcctccttctggtgatcacaaaagctacatcgaatacacaaagactctgccactgaccccagcaccagaaatctttgggatgaatgccaatgcagatatcactaaggatcagtcagaaactcagctgctatttgataacattcttcttacacagtctcgttcagcaggtgctggtgcaaaatcatcagatgaagtagtgaatgaggtcgctagtgacatcttgggcaaacttccaaacaacttcgacatcgaggctgccatgaggaggtacccaacaacttatactcagagcatgaacactgtacttgtccaagagatgggacggttcaataagttactgaagaccataagagattcgtgcgtaaatattcaaaaagcaatcaaggggcttgcagtcatgtctacagatcttgaagaagtggttagcagcattttgaatgtcaaaattccagaaatgtggatgggtaaatcctacccaagccttaaaccacttggcagctatgtgaatgacttccttgcaagactaaaattcttgcagcaatggtatgaggttggtcctcctccagtcttctggctttctggcttcttcttcacacaagccttcctgaccggtgcccagcagaactacgccaggaaatacacaattcctattgatcttcttgggtttgactatgaagtgatggaagacaaagaatacaagcatcctcctgaggatggtgttttcattcacggattatttctggatggagcttcctggaatagaaagatcaagaaacttgcagaatcgcatcccaaaattctttatgatacagtgcctgtgatgtggctaaagccctgtaagagggcagatataccaaaacggccaagttatgttgctccattgtataagacaagtgagcggagaggagtattatccaccactggccattccacgaattttgtgattgccatgactcttccctctgaccaacccaaggaacactggattggacgaggtgtagcactgttatgtcaacttaattcataaccagaagacatcatttccttgttcctatttcttgttggctggctgagtagagaaagcatattattttactacttaaacctttttttttgtttgtttaaatacatttgactaaagttataattatgaatttacttatgagcaaatgcagctaaacttaatatgactcatacttaaatgtaaggaaatgttctgaaataaataaagactaaagaaaacacactggcaaaa

SEQ ID NO: 3940 - DNA, 714 bp, Homo sapiens
  CDS (87)..(590)
aaggatccttaattaaattaatccccccccccccccccgctcttccggttctaggcgcttcgggagccgcggcttatggtgcagacatggccaagtccaagaaccacaccacacacaaccagtcccgaaaatggcacagaaatggtatcaagaaaccccgatcacaaagatacgaatctcttaagggggtggaccccaagttcctgaggaacatgcgctttgccaagaagcacaacaaaaagggcctaaagaagatgcaggccaacaatgccaaggccatgagtgcacgtgccgaggctatcaaggccctcgtaaagcccaaggaggttaagcccaagatcccaaagggtgtcagccgcaagctcgatcgacttgcctacattgcccaccccaagcttgggaagcgtgctcgtgcccgtattgccaaggggctcaggctgtgccggccaaaggccaaggccaaggccaaggccaaggccaaggccaaggcccaggccaaggatcaaaccaaggcccaggctgcagccccagcttcagttccagctcaggctcccaaacgtacccaggcccctacaaaggcttcagagtagatatctctgccaacatgaggacagaaggactggtgcgaccccccacccccgcccctgggctaccatctgcatggggctggggtcctcctgtgctatttgtacaaataaacctgaggcaggaaaa

SEQ ID NO: 3941 - DNA, 3042 bp, Homo sapiens
  CDS (1)..(2286)
atggccctcccagccctgggcctggacccctggagcctcctgggccttttcctcttccaactgcttcagctgctgctgccgacgacgaccgcggggggaggcgggcaggggcccatgcccagggtcagatactatgcaggggatgaacgtagggcacttagcttcttccaccagaagggcctccaggattttgacactctgctcctgagtggtgatggaaatactctctacgtgggggctcgagaagccattctggccttggatatccaggatccaggggtccccaggctaaagaacatgataccgtggccagccagtgacagaaaaaagagtgaatgtgcctttaagaagaagagcaatgagacacagtgtttcaacttcatccgtgtcctggtttcttacaatgtcacccatctctacacctgcggcaccttcgccttcagccctgcttgtaccttcattgaacttcaagattcctacctgttgcccatctcggaggacaaggtcatggagggaaaaggccaaagcccctttgaccccgctcacaagcatacggctgtcttggtggatgggatgctctattctggtactatgaacaacttcctgggcagtgagcccatcctgatgcgcacactgggatcccagcctgtcctcaagaccgacaacttcctccgctggctgcatcatgacgcctcctttgtggcagccatcccttcgacccaggtcgtctacttcttcttcgaggagacagccagcgagtttgacttctttgagaggctccacacatcgcgggtggctagagtctgcaagaatgacgtgggcggcgaaaagctgctgcagaagaagtggaccaccttcctgaaggcccagctgctctgcacccagccggggcagctgcccttcaacgtcatccgccacgcggtcctgctccccgccgattctcccacagctccccacatctacgcagtcttcacctcccagtggcaggttggcgggaccaggagctctgcggtttgtgccttctctctcttggacattgaacgtgtctttaaggggaaatacaaagagttgaacaaagaaacttcacgctggactacttataggggccctgagaccaacccccggccaggcagttgctcagtgggcccctcctctgataaggccctgaccttcatgaaggaccatttcctgatggatgagcaagtggtggggacgcccctgctggtgaaatctggcgtggagtatacacggcttgcagtggagacagcccagggccttgatgggcacagccatcttgtcatgtacctgggaaccaccacagggtcgctccacaaggctgtggtaagtggggacagcagtgctcatctggtggaagagattcagctgttccctgaccctgaacctgttcgcaacctgcagctggcccccacccagggtgcagtgtttgtaggcttctcaggaggtgtctggagggtgccccgagccaactgtagtgtctatgagagctgtgtggactgtgtccttgcccgggacccccactgtgcctgggaccctgagtcccgaacctgttgcctcctgtctgcccccaacctgaactcctggaagcaggacatggagcgggggaacccagagtgggcatgtgccagtggccccatgagcaggagccttcggcctcagagccgcccgcaaatcattaaagaagtcctggctgtccctaactccatcctggagctcccctgcccccacctgtcagccttggcctcttattattggagtcatggcccagcagcagtcccagaagcctcttccactgtctacaatggctccctcttgctgatagtgcaggatggagttgggggtctctaccagtgctgggcaactgagaatggcttttcataccctgtgatctcctactgggtggacagccaggaccagaccctggccctggatcctgaactggcaggcatcccccgggagcatgtgaaggtcccgttgaccagggtcagtggtggggccgccctggctgcccagcagtcctactggccccactttgtcactgtcactgtcctctttgccttagtgctttcaggagccctcatcatcctcgtggcctccccattgagagcactccgggctcggggcaaggttcagggctgtgagaccctgcgccctggggagaaggccccgttaagcagagagcaacacctccagtctcccaaggaatgcaggacctctgccagtgatgtggacgctgacaacaactgcctaggcactgaggtagcttaaactctaggcacaggccggggctgcggtgcaggcacctggccatgctggctgggcggcccaagcacagccctgactaggatgacagcagcacaaaagaccacctttctcccctgagaggagcttctgctactctgcatcactgatgacactcagcagggtgatgcacagcagtctgcctcccctatgggactcccttctaccaagcacatgagctctctaacagggtgggggctacccccagacctgctcctacactgatattgaagaacctggagaggatccttcagttctggccattccagggaccctccagaaacacagtgtttcaagagaccctaaaaaacctgcctgtcccaggaccctatggtaatgaacaccaaacatctaaacaatcatatgctaacatgccactcctggaaactccactctgaagctgccgctttggacaccaacactcccttctcccagggtcatgcagggatctgctccctcctgcttcccttaccagtcgtgcaccgctgactcccaggaagtcttccctgaagtctgaccacctttcttcttgcttcagttggggcagactctgatcccttctgccctggcagaatggcaggggtaatctgagccttcttcactcctttaccctagctgaccccttcacctctccccctcccttttcctttgttttgggattcagaaaactgcttgtcagagactgtttattttttattaaaaatataaggcttatgtatgaaa

SEQ ID NO: 3942 - DNA, 1557 bp, Homo sapiens
  CDS (802)..(1230)
  misc_feature (1)...(1557): n = a,t,c or g
atggaggagtcttgggaggctgcgcccggaggccaagccggggcagagctcccaatggagcccgtgggaagcctggtccccacgctggagcagccgcaggtgcccgcgaaggtgcgacaacctgaaggtcccgaaagcagcccaagtccggccggggccgtggagaaggcggcgggcgcaggcctggagccctcgagcaagaaaaagccgccttcgcctcgccccgggtccccgcgcgtgccgccgctcagcctgggctacggggtctgccccgagccgccgtcaccgggccctgccttggtcaagctgccccggaatggcgaggcgcccggggctgagcctgcgcccagcgcctgggcgcccatggagctgcaggtagatgtgcgcgtgaagcccgtgggcgcggccggtggcagcagcacgccatcgcccaggccctccacgcgcttcctcaaggtgccggtgcccgagtcccctgccttctcccgccacgcggacccggcgcaccagctcctgctgcgcgcaccatcccagggcggcacgtggggccgccgctcgccgctggctgcagcccggacggagagcggctgcgacgcagagggccgggccagccccgcggaaggaagcgccggctccccgggctcccccacgtgctgccgctgcaaggagctggggctggagaaggaggatgcggcgctgttgccccgcgcggggttggacggcgacgagaagctgccccgggccgtaacgcttacggggctacccatgtacgtgaagtccctgtactgggccctggcgttcatggctgtgctcctggcagtctctggggttgtcattgtggtcctggcctcaagagcaggagccagatgccagcagtgccccccaggctgggtgttgtccgaggagcactgttactacttctctgcagaagcgcaggcctgggaagccagccaggctttctgctcagcctaccacgctaccctccccctgctaagccacacccaggacttcctgggcagatacccagtctccaggcactcctgggtgggggcctggcgaggcccccagggctggcactggatcgacgaggccccactcccgccccagctactccctgaggacggcgaggacaatctggatatcaactgtggggccctggaggaaggcacgctggtggctgcaaactgcagcactccaagaccctgggtctgtgccaaggggacccagtgatctgggctctgcctggtcctcagcctgccaggcagatgcagcaccccctacaggggaggccagttgagagcttgggcagcctcttcctggacccagttatccaggtcttcatgctctgctcaagggggccacatgagcgagcctaggagctggacttcaacccaggaagatgcatccgagggaaaggagattttctatggcctcaggcctgagtgccaatattagtctccagcttctgtggatgatcggtttgatgacattgngatggttgtttagcatttctgtgccttggtttcattanaatgacaatttccccctaaaagaaaa

SEQ ID NO: 3943 - protein, 379 aa, Homo sapiens
MAVALVRERDLSFPGVGDAVVNPTRWHLPAQPEMLYEGGEGRMETLKDKTLQELEELQNDSEAIDQLALESPEVQDLQLEREMALATNRSLAERNLEFQGPLEISRSNLSDRYQELRKLVERCQEQKAKLEKFSSALQPGTLLDLLQVEGMKIEEESEAMAEKFLEGEVPLETFLENFSSMRMLSHLRRVRVEKLQEVVRKPRASQELAGDAPPPRPPPPVRPVPQGTPPVVEEQPQPPLAMPPYPLPYSPSPSLPVGPTAHGALPPAPFPVVSQPSFYSGPLGPTYPAAQLGPRVPPTLNLWPSHRRDSRVNWKWRWCSLWTCVGTQRPWRDKALGGVTGHGTCWPSGQRSSWKPLLSVPGCSGASQAGVQHLSPVSV

SEQ ID NO: 3944 - protein, 860 aa, Homo sapiens [sequence omitted]

SEQ ID NO: 3945 - protein, 1774 aa, Homo sapiens
MYEDFHELFQRLDFDNDGMVEADDLRSLMFCDFHDPKREDTNYREIADVDNLRMIVEIHLEEYNNISKKPMNLVLFRFAIEHISRISRILKQPRSHALLVGVGGSGRQSVTRLAAHMADYSVFQVEISKGYDTTEWHEDLKVILRKCAEDTQIKEESFLEDVSNLLNAGEIPNLFALDEKQEICDKMRQLDRQRDKTKQTDGSPIALFNMFIDHCRSQLHVVLAMSPIGDAFRNRLRKFPALVNCCTIDWFQSWPEDALQAVASRFLEEIEMSEEIRDGCIDMCKSFHTSTIDLSKSFFVELQRYNYVTPTSYLELISTFKLLLEKKRSEVMKMKKRYEVGLEKLDSASSQVATMQMELEALHPQLKVASKEVDEMMIMIEKESVEVAKTEKIVKADETIANEQAMASKAIKDECDADLAGALPILESALAALDTLTAQDITVVKSMKSPPAGVKLVMEAICILKGIKADKIPDPTGSGKKIEDFWGPAKRLLGDMRFLQSLHEYDKDNIPPAYMNIIRKNYIPNPDFVPEKIRNASTAAEGLCKWVIAMDSYDKVAKIVAPKKIKLAAAEGELKIAMDGLRKKQAALKEVQDKLARLQDTLELNKQKKADLENQVDLCSKKLERAEQLIGGLGGEKTRWSHTALELGQLYINLTGDILISSGVVAYLGAFTSTYRQNQTKEWTTLCKGRDIPCSDDCSLMGTLGEAVTIRTWNIAGLPSDSFSIDNGIIIMNARRWPLMIDPQSQANKWIKNMEKANSLYVIKLSEPDYVRTLENCIQFGTPVLLENVGEELDPILEPLLLKQTFKQGGSTCIRLGDSTIEYAPDFRFYITTKLRNPHYLPETSVKVTLLNFMITPEGMQDQLLGIVVAQERPDLEEEKQALILQGAENKRQLKEIEDKILEVLSSSEGNILEDETAIKILSSSKALANEISQKQEVAEETEKKIDTTRMGYRPIAIHSSILFFSLADLANIEPMYQYSLTWFINLFILSIENSEKSEILAKRLQILKDHFTYSLYVNVCRSLFEKDKLLFSFCLTINLLLHERAINKAEWRFLLTGGIGLDNPYANPCTWLPQKSWDEICRLDDLPAFKTIRREFMRLKDGWKKVYDSLEPHHEVFPEEWEDKANEFQRMLIIRCLRPDKVIPMLQEFIINRLGRAFIEPPPFDLAKAFGDSNCCAPLIFVLSPGADPMAALLKFADDQGYGGSKLSSLSLGQGQGPIAMKMLEKAVKEGTWVVLQNCHLATSWMPTLEKVCEELSPESTHPDFRMWLTSYPSPNFPVSVLQNGVKMTNEAPKGLRANIIRSYLMDPISDPEFFGSCKKPEEFKKLLYGLCFFHALVQERRKFGPLGWNIPYEFNETDLRISVQQLHMFLNQYEELPYEALRYMTGECNYGGRVTDDWDRRTLRSILNKFFNPELVENSDYKFDSSGIYFVPPSGDHKSYIEYTKTLPLTPAPEIFGMNANADITKDQSETQLLFDNILLTQSRSAGAGAKSSDEVVNEVASDILGKLPNNFDIEAAMRRYPTTYTQSMNTVLVQEMGRFNKLLKTIRDSCVNIQKAIKGLAVMSTDLEEVVSSILNVKIPEMWMGKSYPSLKPLGSYVNDFLARLKFLQQWYEVGPPPVFWLSGFFFTQAFLTGAQQNYARKYTIPIDLLGFDYEVMEDKEYKHPPEDGVFIHGLFLDGASWNRKIKKLAESHPKILYDTVPVMWLKPCKRADIPKRPSYVAPLYKTSERRGVLSTTGHSTNFVIAMTLPSDQPKEHWIGRGVALLCQLNS

SEQ ID NO: 3946 - protein, 167 aa, Homo sapiens
MAKSKNHTTHNQSRKWHRNGIKKPRSQRYESLKGVDPKFLRNMRFAKKHNKKGLKKMQANNAKAMSARAEAIKALVKPKEVKPKIPKGVSRKLDRLAYIAHPKLGKRARARIAKGLRLCRPKAKAKAKAKAKAKAQAKDQTKAQAAAPASVPAQAPKRTQAPTKASE

SEQ ID NO: 3947 - protein, 761 aa, Homo sapiens
MALPALGLDPWSLLGLFLFQLLQLLLPTTTAGGGGQGPMPRVRYYAGDERRALSFFHQKGLQDFDTLLLSGDGNTLYVGAREAILALDIQDPGVPRLKNMIPWPASDRKKSECAFKKKSNETQCFNFIRVLVSYNVTHLYTCGTFAFSPACTFIELQDSYLLPISEDKVMEGKGQSPFDPAHKHTAVLVDGMLYSGTMNNFLGSEPILMRTLGSQPVLKTDNFLRWLHHDASFVAAIPSTQVVYFFFEETASEFDFFERLHTSRVARVCKNDVGGEKLLQKKWTTFLKAQLLCTQPGQLPFNVIRHAVLLPADSPTAPHIYAVFTSQWQVGGTRSSAVCAFSLLDIERVFKGKYKELNKETSRWTTYRGPETNPRPGSCSVGPSSDKALTFMKDHFLMDEQVVGTPLLVKSGVEYTRLAVETAQGLDGHSHLVMYLGTTTGSLHKAVVSGDSSAHLVEEIQLFPDPEPVRNLQLAPTQGAVFVGFSGGVWRVPRANCSVYESCVDCVLARDPHCAWDPESRTCCLLSAPNLNSWKQDMERGNPEWACASGPMSRSLRPQSRPQIIKEVLAVPNSILELPCPHLSALASYYWSHGPAAVPEASSTVYNGSLLLIVQDGVGGLYQCWATENGFSYPVISYWVDSQDQTLALDPELAGIPREHVKVPLTRVSGGAALAAQQSYWPHFVTVTVLFALVLSGALIILVASPLRALRARGKVQGCETLRPGEKAPLSREQHLQSPKECRTSASDVDADNNCLGTEVA

SEQ ID NO: 3948 - protein, 142 aa, Homo sapiens
MAVLLAVSGVVIVVLASRAGARCQQCPPGWVLSEEHCYYFSAEAQAWEASQAFCSAYHATLPLLSHTQDFLGRYPVSRHSWVGAWRGPQGWHWIDEAPLPPQLLPEDGEDNLDINCGALEEGTLVAANCSTPRPWVCAKGTQ

SEQ ID NO: 3949 - DNA, 1465 bp, Homo sapiens
agcccatggactctgggtccccgaaggacatctcaggaaccccctagttctctactttgagacatatgcggtggctggggtcactctgagaagtgtcactttggacttgtcccttgcgttgggtgatggagtcagacaccaccagcagtggatggccaagcttcaagggcaccttcttagcagctctgtgggctgtgggcaaaagactttcctgttctcccttctccatattagggacccagggaagtgcttgctgcttccagcctcgctgatggctctgaggagcaggtgatggctgtggcattggtgagagaaagggacctgtcatttccaggggtgggtgatgctgtggtaaaccccacaaggtggcacttgcctgcccagcctgagatgctgtatgagggcggtgagggaaggatggagacgctgaaggataagaccctgcaggagctggaggagttgcagaatgactcggaggcgattgaccagctggccctggagtcccctgaggtccaggacctacagctggaacgggagatggcactggccaccaaccggagcctggcagagcggaacttggagttccagggtcccctggagatcagccgctcaaacctctcggatagataccaggagctccggaagctcgtggagcggtgccaggagcagaaggcaaagctggagaaattttcttcagcactgcagccagggaccttgttagaccttctgcaggtggaaggcatgaagatcgaagaagagtccgaggccatggctgagaagttcctggagggcgaggtgcccctggaaacgttcctggagaatttttcctccatgaggatgctgtcccacctgcgccgggttcgcgtggaaaagctccaggaagtggtgaggaagcccagggcttcccaggagctggccggcgatgcccctccaccccgttcaccacccccggtgcgcccagtcccccagggaacaccccctgtggttgaagagcagccgcagccaccattagccatgcctccctaccctttgccctacagcccatcccccagcctgcctgtgggccccactgcccatggagccctgccaccggcccctttcccagtagtgtcccagccctccttctacagcgggcctctgggccccacttacccggcagcccagcttggacccaggggtgctgcgggttactcctggtccccacagaggagcatgccgcccctccctatgggttcccaccaccgccggggcctgcctggcctgggtattagacacactcctggccctcggcccctccctagtcccacccacgctcaacctttggcccagccatcgccgagattcgagggtcaactggaagtggcgttggtgctccctgtggacttgcgtcggcctacgtgccatccgcgtgacgctaggtcagcgctgccgggtctttaccaaatgtgcttgcttctcctaagat

SEQ ID NO: 3950 - DNA, 819 bp, Homo sapiens
tttttttttggtggattttgtaaaccatcatttactttgtctttacttttttttgcaaagatagttgtgctgccaagcaacttgaggtaaaggcattaaaagggttagactacaagaaatgaaaacaaaacaattgcgatacttcctataggagaccgcacaaaaagcagttggctggtttcatattgcataatgatgctgtgttccttgatgaagtaaacaatcttccttgtattaacataaggatcagaccttggcccccacacagtgttggtttctgtatggctggaggtgtccttactcaattgacttcactggaaacatacgttgtatgtcaattcatctttcagtacttcctctcagagaatatacttggactatttaagcgaagtacattgtgcgtaaggtatcttggtgaatctgtacagccttggcaagagcttgtggatctcgcccattgctttgtcctgaaacgtgacttccttcagcactgtcatgttctttgtccacaagatgatatctggctctaaatgctaccaggtgagcataatacgctggtgcaggtatagaaacagatcgtgtacagcgtacgtaagtgtggcagagctggtaagttagcagctgaagttcatctgcagtaaagcagttatcatgccctctccctgatagtggaagggcgactgctccgctgtattccagcatggttcgagaggtaagaatggccctcctatgggtgtgtaacgtcagcctcatctgttgttccagctgggatataaaaaaaaattccaaccctttctgtcctatcagcacaaatcgaaa

SEQ ID NO: 3951 - DNA, 4620 bp, Homo sapiens
tttttgccagtgtgttttctttagtctttatttatttcagaacatttccttacatttaagtatgagtcatattaagtttagctgcatttgctcataagtaaattcataattataactttagtcaaatgtatttaaacaaacaaaaaaaaaaaggtttaagtagtaaaataatatgctttctttactcagccagccaacaagaaataaataggaacaaggaaatgatgtcttctggttatgaattaagttgacataacagtgctacacctcgtccaatccagtgttccttgggttggtcagagggaagagtcattggcaatcacaaaattcgtggaatggccagtggtggataatactcctctccgctcacttgtcttatacaatggagcaacataacttggccgttttggtatatctgccctcttacagggctttagccacatcacaggcactgtatcataaagaattttgggatgcgattctgcaagtttcttgatctttctattccaggaagctccatccagaaataatccgtgaatgaaaacaccatcctcaggaggatgcttgtattctttgtcttccatcacttcatagtcaaacccaagaagatcaataggaattgtgtatttcctggcgtagttctgctgggcaccggtcaggaaggcttgtgtgaagaagaagccagaaagccagaagactggaggaggaccaacctcataccattgctgcaagaattttagtcttgcaaggaagtcattcacatagctgccaagtggtttaaggcttgggtaggatttacccatccacatttctggaattttgacattcaaaatgctgctaaccacttcttcaagatctgtagacatgactgcaagccccttgattgctttttgaatatttacgcacgaatctcttatggtcttcagtaacttattgaaccgtcccatctcttggacaagtacagtgttcatgctctgagtataagttgttgggtacctcctcatggcagcctcgatgtcgaagttgtttggaagtttgcccaagatgtcactagcgacctcattcactacttcatctgatgattttgcaccagcacctgctgaacgagactgtgtaagaagaatgttatcaaatagcagctgagtttctgactgatccttagtgatatctgcattggcattcatcccaaagatttctggtgctggggtcagtggcagagtctttgtgtattcgatgtagcttttgtgatccccagaaggaggaacaaaatagatgccacttgagtcgaacttatagtctgaattttcaactaattcgggattgaagaatttgtttagaatgctgcgcagcgtgcgccggtcccagtcatcggtcactctacctccgtaattgcattcgccagtcatgtaccgcagagcctcatacggcagttcctcatactggttcaggaacatgtggagttgctgtacgctgattctcagatctgtctcattgaactcataaggaatattccaccataggggtccaaatttccgtctttcttgtaccaaagcatgaaagaaacacaggccataaagcaatttcttgaattcctcaggctttttgcagctgccaaagaactccggatcagagatcgggtccatgaggtatgatcgaatgatattagcccgtaaaccttttggtgcttcattggtcattttcactccattctgcagtactgacacagggaaatttggagatgggtaactcgttagccacattcggaaatctggatgtgttgactctgggcttaactcctcacagactttctcaagggttggcatccaagaggtggcaaggtgacaattctgaagaacaacccatgttccttccttgacagctttttctaacatcttcatagcaatgggcccttggccttgaccaagagataaagagctaagttttgatcccccatatccctggtcatcagcaaattttagaagggcagccatgggatctgctccaggagagagcacgaaaatcagtggtgcacagcagttactgtctccaaatgccttggctaaatcaaaggggggtggttcaatgaatgcacgtcccaatctgttgattataaattcctgcaacattggaataaccttgtctggcctcaagcaacgaataataagcatcctttgaaactcatttgctttatcttcccattcttcagggaaaacctcatggtgtggttccaaactatcatatactttcttccatccatcctttaagcgcataaactctctacgaatggttttgaaggcaggcaaatcatctaatcgacatatttcatcccaggatttctgaggaagccatgtacaagggttggcataaggattatccagtccaatgccaccagttagcagaaatctccactcagctttattaatcgcccgctcatgcagcagtagatttatggttagacaaaaggaaaagagcagcttatccttttcaaagagtgaccggcagacattaacatacagtgaataagtaaagtgatccttgagaatctgaagcctttttgccaaaatttctgatttctctgaattttcaatagacaggatgaaaaggttaataaaccaggtcagtgaatactggtacatgggctcaatgttggctaaatcagcaagagaaaaaaataggatggaagaatggatggcaataggacgatagcccatgcgggtggtgtcaatctttttctctgtctcttcggctacttcctgcttctgagaaatctcattagccaaggccttggaggaagataatatcttaatagcagtttcatcttctaatatattgccttccgaagatgaaagaacttctaaaatcttgtcttctatttcttttaactgccttttattttcagctccttgtaatatcaaggcttgcttttcttcttcaaggtctggcctttcttgtgccaccacaattcccagaagctgatcttgcattccctcaggggttatcatgaagtttaataatgttacctttactgatgtttcaggaagataatgaggatttcttaacttggtagtaatatagaagcggaagtcaggtgcatattcaattgtggagtccccaagccggatacatgtactcccaccctgcttaaaggtttgttttagtagaagaggttccaaaataggatctagttcttcgccaacattttctagcaacacaggagtaccaaactggatgcaattttccagagtcctgacatagtcaggttcactaagtttaatcacataaagactattggctttttccatgttcttgatccatttattagcctgactttgaggatctatcatcagaggccaccttcttgcattcattatgattatcccattatcaatggaaaatgagtcagaaggtaatccagcaatattccaagttcgaattgtcacagcttctcccagggtacccataagagagcaatcatctgagcaggggatatctcttcctttgcacaaagttgtccactctttagtttgattctgtctataggtggatgtgaaggctccgaggtaagcaaccactccggaggaaatgaggatatccccagtcaagttgatgtacagctgacctagctccagagctgtgtggctccatcgagttttctcacctccaaggcctccaatcaactgttcagctcgttctagttttttgctgcaaaggtcaacctggttttccaggtcagccttcttttgtttatttaattcaagtgtgtcttgaagcctggccagcttgtcctgaacttccttaagggctgcctgcttctttctaagaccatccatggcaattttaagctccccttcagctgcagccagttttatctttttgggagctactatttttgccactttatcatatgaatccattgctatgacccatttgcacagaccttcggccgctgtagaagcatttctgattttttctggtacaaaatctggatttggaatataattttttcttatgatattcatataagctggaggaatattgtccttgtcatattcatgaagtgactgcagaaacctcatgtcaccaagaagtctcttagctgggccccagaaatcctcaatttttttccctgaacctgttgggtcagggattttgtcagctttgattcctttcaagatgcatatagcttccataacaagcttgacaccagcaggaggactcttcatggattttaccactgtaatatcctgtgcagtaagagtatcaagggcggccagtgctgactctaatattggcaaggcacctgccaggtcagcatcgcactcatctttgatggctttggaagccatagcttgttcattcgctattgtttcatcagctttcactattttttcagttttggcaacttctacagactctttctcaatcattatcatcatttcatcaacctctttgctagcaacttttaattgaggatgtagtgcctccaactccatctgcattgtggctacttgagatgaagcagaatccagtttctccaaacccacttcatatctctttttcattttcattacttcacttcttttcttttctaacaacagtttgaaggtggagattaattcg

SEQ ID NO: 3952 - DNA, 648 bp, Homo sapiens
tctggttctaggtgcttcaggagctgtggcttaaggtgcagacatggccaagtccaagaaccacaccacacacaaccagtcccgaaaatggcacagaaatgtcatcaagaaacccctatcacaaagatacaaatctcttaagggggtggaccccaagttcctggggaacatgtgctttaccaagaagcacaagaagaagggcctaaagaagatgcaggccgacagtgccaaggccgtgagtacatgtgccaaggctatcgaggccctcgtaaagcccaaagaggttaagcccaagatcccaaagggtgtcagctgtgagctcaattgacttgcctacattgcctaccccaaattttggacgtgtgcttgtgcctgcattgccaaagggctcaggctgtgccagccaaaggccaaggcccaggaccaaaccaaggcccaggtccaaatcaaggcccaggctgcagctccagcttcagttccaactcaggctcccaaaggtgcccaggcccctacaaaggcttcagggtagagatctctgtctgccaatatgaggacagaaggactggggtgaccccctgggctgccgtctgcatggggctggtgtcctcctgtgctatttgtacaaataaacctgaggcaggattcgtt

SEQ ID NO: 3953 - DNA, 1901 bp, Homo sapiens
tttttttttttaagccttatatttttaataaaaaataaacagtctctgacaagcagttttctgaatcccaaaacaaaggaaaagggagggggagaggtgaaggggtcagctagggtaaaggagtgaagaaggctcagattacccctgccattctgccagggcagaagggatcagagtctgccccaactgaagcaagaagaaaggtggtcagacttcaggaaagacttcctgggagtcagccggtgcacgactggtaagggaagcaggagggagcagatccctgcatgaccctgggagaagggagtgttggtgtccaaagcggcagcttcagagtggagtttccaggagtggcatgttagcatatgattgtttagatgtttggtgttcattaccatagggtcctgggacaggcaggttttttagggtctcttgaaacactgtgtttctggagggtccctggaatggccagaactgaaggatcctctccaggttcttcaatatcagtgtaggagcaggtctgggggtagccccccccctgttagagagctcatgtgcttggtagaagggagtcccataggggaggcagactgctgtgcatcaccctgctgagtgtcatcagtgatgcagagtagcagaagctcctctcaggggagaaaggtggtcttttgtgctgctgtcatcctagtcagggctgtgcttgggcccgccccagccagcatggcccaggtgcctgcaccgcagccccggcctgtgcctagagtttaagctacctcagtgcctaggcagttgttgtcagcgtccacatcactggcagaggtcctgcattccttgggagactggaggtgttgctctctgcttaacggggccttctccccagggcgcagggtctcacagccctgaaccttgccccgagcccggagtgctctcaatggggaggccacgaggatgatgagggctcctgaaagcactaaggcaaagaggacagtgacagtgacaaagtggggccagtaggactgctgggcagccagggcggccccaccactgaccctggtcaacgggaccttcacatgctcccgggggatgcctgccagttcaggatccagggccagggtctggtcctggctgtccacccagtaggagatcacagggtatgaaaagccattctcagttgcccagcactggtagagacccccaactccatcctgcactatcagcaagagggagccattgtagacagtggaagaggcttctgggactgctgctgggccatgactccaataataagaggccaaggctgacaggtgggggcaggggagctccaggatggagttagggacagccaggacttctttaatgatttgcgggcggctctgaggccgaaggctcctgctcatggggccactggcacatgcccactctgggttcccccgctccatgtcctgcttccaggagttcaggttgggggcagacaggaggcaacaggttcgggactcagggtcccaggcacagtgggggtcccgggcaaggacacagtccacacagctctcatagacactacagttggctcggggcaccctccagacacctcctgagaagcctacaaacactgcaccctgggtgggggccagctgcaggttgcgaacaggttcagggtcagggaacagctgaatctcttccaccagatgagcactgctgtccccacttaccacagccttgtggagcgaccctgtggtgattcccaggtacatgacaagatggctgcggacgcgtgggcggacgcgtgggtcgaccgggattccgggaggactacacgtcaaggtggctcttgagattctagtactagatgcgataagtagattagtgcgaagtagtaataccaataatcatacataaaccgcgat

SEQ ID NO: 3954 - DNA, 823 bp, Homo sapiens
tcttatgcagcaccgagcctgttcgtgaagtccctgtactgggccctggcgttcatggctgtgctcctggcagtctctggggttgtcattgtggtcctggcctcaagagcaggagccagatgccagcagtgccccccaggctgggtgttgtccgaggagcactgttactacttctctgcagaagcgcaggcctgggaagccagccaggctttctgctcagcctaccacgctaccctccccctgctaagccacacccaggacttcctgggcagatacccagtctccaggcactcctgggtgggggcctggcgaggcccccagggctggcactggatcgacgaggccccactcccgccccagctactccctgaggacggcgaggacaatctggatatcaactgtggggccctggaggaaggcacgctggtggctgcaaactgcagcactccaagaccctgggtctgtgccaaggggacccagtgatctgggctctgcctggtcctcagcctgccaggcagatgcagcaccccctacaggggaggccagttgagagcttgggcagcctcttcctggacccagttatccaggtcttcatgctctgctcaagggggccacatgagcgagcctaggagctggacttcaacccaggaagatgcatccgagggaaaggagattttctatggcctcaggcctgagtgccaatattagtctccagcttctgtggatgatcggtttgatgacattgggatggttgtttagcatttctgtgccttggtttcattaaaatgacaatttccccctagaggaaaaagacagggttaac

SEQ ID NO: 3955 - protein, 345 aa, Homo sapiens
  misc_feature (1)...(345): Xaa = any amino acid or nothing
GPREVLAASSLADGSEEQVMAVALVRERDLSFPGVGDAVVNPTRWHLPAQPEMLYEGGEGRMETLKDKTLQELEELQNDSEAIDQLALESPEVQDLQLEREMALATNRSLAERNLEFQGPLEISRSNLSDRYQELRKLVERCQEQKAKLEKFSSALQPGTLLDLLQVEGMKIEEESEAMAEKFLEGEVPLETFLENFSSMRMLSHLRRVRVEKLQEVVRKPRASQELAGDAPPPRSPPPVPPSPPGNTPCGXRAAAATISHASLPFALQPIPQPACGPHCPWSPATGPFPSSVPALLLQRASGPHLPGSPAWTQGCCGLLLVPTEEHAAPPYGFPPPPGPAWPGY

SEQ ID NO: 3956 - protein, 145 aa, Homo sapiens
  misc_feature (1)...(145): Xaa = any amino acid or nothing
SICADRTERVGIFFYIPAGTTDEADVTHPXEGHSYLSNHAGIQRSSRPSHYQGEWHDNCFTADELQLLTYQLCHTYVRCTRSVSIPAPAYYAHLVAFRARYHLVDKEHDSAEGSHVSGQSNGRDPQALAKAVQIHQDTLRTMYFA

SEQ ID NO: 3957 - protein, 1460 aa, Homo sapiens
ELISTFKLLLEKKRSEVMKMKKRYEVGLEKLDSASSQVATMQMELEALHPQLKVASKEVDEMMIMIEKESVEVAKTEKIVKADETIANEQAMASKAIKDECDADLAGALPILESALAALDTLTAQDITVVKSMKSPPAGVKLVMEAICILKGIKADKIPDPTGSGKKIEDFWGPAKRLLGDMRFLQSLHEYDKDNIPPAYMNIIRKNYIPNPDFVPEKIRNASTAAEGLCKWVIAMDSYDKVAKIVAPKKIKLAAAEGELKIAMDGLRKKQAALKEVQDKLARLQDTLELNKQKKADLENQVDLCSKKLERAEQLIGGLGGEKTRWSHTALELGQLYINLTGDILISSGVVAYLGAFTSTYRQNQTKEWTTLCKGRDIPCSDDCSLMGTLGEAVTIRTWNIAGLPSDSFSIDNGIIIMNARRWPLMIDPQSQANKWIKNMEKANSLYVIKLSEPDYVRTLENCIQFGTPVLLENVGEELDPILEPLLLKQTFKQGGSTCIRLGDSTIEYAPDFRFYITTKLRNPHYLPETSVKVTLLNFMITPEGMQDQLLGIVVAQERPDLEEEKQALILQGAENKRQLKEIEDKILEVLSSSEGNILEDETAIKILSSSKALANEISQKQEVAEETEKKIDTTRMGYRPIAIHSSILFFSLADLANIEPMYQYSLTWFINLFILSIENSEKSEILAKRLQILKDHFTYSLYVNVCRSLFEKDKLLFSFCLTINLLLHERAINKAEWRFLLTGGIGLDNPYANPCTWLPQKSWDEICRLDDLPAFKTIRREFMRLKDGWKKVYDSLEPHHEVFPEEWEDKANEFQRMLIIRCLRPDKVIPMLQEFIINRLGRAFIEPPPFDLAKAFGDSNCCAPLIFVLSPGADPMAALLKFADDQGYGGSKLSSLSLGQGQGPIAMKMLEKAVKEGTWVVLQNCHLATSWMPTLEKVCEELSPESTHPDFRMWLTSYPSPNFPVSVLQNGVKMTNEAPKGLRANIIRSYLMDPISDPEFFGSCKKPEEFKKLLYGLCFFHALVQERRKFGPLWWNIPYEFNETDLRISVQQLHMFLNQYEELPYEALRYMTGECNYGGRVTDDWDRRTLRSILNKFFNPELVENSDYKFDSSGIYFVPPSGDHKSYIEYTKTLPLTPAPEIFGMNANADITKDQSETQLLFDNILLTQSRSAGAGAKSSDEVVNEVASDILGKLPNNFDIEAAMRRYPTTYTQSMNTVLVQEMGRFNKLLKTIRDSCVNIQKAIKGLAVMSTDLEEVVSSILNVKIPEMWMGKSYPSLKPLGSYVNDFLARLKFLQQWYEVGPPPVFWLSGFFFTQAFLTGAQQNYARKYTIPIDLLGFDYEVMEDKEYKHPPEDGVFIHGLFLDGASWNRKIKKLAESHPKILYDTVPVMWLKPCKRADIPKRPSYVAPLYKTSERRGVLSTTGHSTNFVIAMTLPSDQPKEHWIGRGVALLCQLNS

SEQ ID NO: 3958 - protein, 164 aa, Homo sapiens
  misc_feature (1)...(164): Xaa = any amino acid or nothing
GADMAKSKNHTTHNQSRKWHRNVIKKPLSQRYKSLKGVDPKFLGNMCFTKKHKKKGLKKMQADSAKAVSTCAKAIEALVKPKEVKPKIPKGVSCELNXLAYIAYPKFWTCACACIAKGLRLCQPKAKAQDQTKAQVQIKAQAAAPASVPTQAPKGAQAPTKASG

SEQ ID NO: 3959 - protein, 373 aa, Homo sapiens
LLVLLLRTNLLIASSTRISRATLTCSPPGIPVDPRVRPRVRSHLVMYLGITTGSLHKAVVSGDSSAHLVEEIQLFPDPEPVRNLQLAPTQGAVFVGFSGGVWRVPRANCSVYESCVDCVLARDPHCAWDPESRTCCLLSAPNLNSWKQDMERGNPEWACASGPMSRSLRPQSRPQIIKEVLAVPNSILELPCPHLSALASYYWSHGPAAVPEASSTVYNGSLLLIVQDGVGGLYQCWATENGFSYPVISYWVDSQDQTLALDPELAGIPREHVKVPLTRVSGGAALAAQQSYWPHFVTVTVLFALVLSGALIILVASPLRALRARGKVQGCETLRPGEKAPLSREQHLQSPKECRTSASDVDADNNCLGTEVA

SEQ ID NO: 3960 - protein, 160 aa, Homo sapiens
SYAAPSLFVKSLYWALAFMAVLLAVSGVVIVVLASRAGARCQQCPPGWVLSEEHCYYFSAEAQAWEASQAFCSAYHATLPLLSHTQDFLGRYPVSRHSWVGAWRGPQGWHWIDEAPLPPQLLPEDGEDNLDINCGALEEGTLVAANCSTPRPWVCAKGTQ
